United States Patent Application Publication US 2025/0197859 A1 - sequence listing, part 2

SEQ ID NO: 11642 - RNA, 21 nt, synthetic construct
  source 1..21: mol_type = other RNA
  modified_base 1: mod_base = OTHER; note = 5' vinyl phosphonate; note = 2-O-methyl modified nucleoside
  modified_base 3: mod_base = OTHER; note = 2-O-methyl modified nucleoside
  modified_base 5: mod_base = OTHER; note = 2-O-methyl modified nucleoside
  modified_base 7: mod_base = OTHER; note = 2-O-methyl modified nucleoside
  modified_base 9: mod_base = OTHER; note = 2-O-methyl modified nucleoside
  modified_base 11: mod_base = OTHER; note = 2-O-methyl modified nucleoside
  modified_base 13: mod_base = OTHER; note = 2-O-methyl modified nucleoside
  modified_base 15: mod_base = OTHER; note = 2-O-methyl modified nucleoside
  modified_base 17: mod_base = OTHER; note = 2-O-methyl modified nucleoside
  modified_base 19: mod_base = OTHER; note = 2-O-methyl modified nucleoside
  modified_base 20: mod_base = OTHER; note = 2-O-methyl modified nucleoside
  modified_base 21: mod_base = OTHER; note = 2-O-methyl modified nucleoside
  modified_base 2: mod_base = OTHER; note = 2-fluoro-modified nucleoside
  modified_base 4: mod_base = OTHER; note = 2-fluoro-modified nucleoside
  modified_base 6: mod_base = OTHER; note = 2-fluoro-modified nucleoside
  modified_base 8: mod_base = OTHER; note = 2-fluoro-modified nucleoside
  modified_base 10: mod_base = OTHER; note = 2-fluoro-modified nucleoside
  modified_base 12: mod_base = OTHER; note = 2-fluoro-modified nucleoside
  modified_base 14: mod_base = OTHER; note = 2-fluoro-modified nucleoside
  modified_base 16: mod_base = OTHER; note = 2-fluoro-modified nucleoside
  modified_base 18: mod_base = OTHER; note = 2-fluoro-modified nucleoside
  modified_base 1^2: mod_base = OTHER; note = phosphorothioate linkage
  modified_base 2^3: mod_base = OTHER; note = phosphorothioate linkage
  modified_base 19^20: mod_base = OTHER; note = phosphorothioate linkage
  modified_base 20^21: mod_base = OTHER; note = phosphorothioate linkage
tgccgaacaatttttgtgttt

SEQ ID NO: 11643 - RNA, 19 nt, synthetic construct
  source 1..19: mol_type = other RNA
ggctctgcattttcatcgt

SEQ ID NO: 11644 - RNA, 19 nt, synthetic construct
  source 1..19: mol_type = other RNA
tttcatcgtggcctttgtc

SEQ ID NO: 11645 - RNA, 19 nt, synthetic construct
  source 1..19: mol_type = other RNA
catctctggagtgtataag

SEQ ID NO: 11646 - RNA, 19 nt, synthetic construct
  source 1..19: mol_type = other RNA
atctctggagtgtataagc

SEQ ID NO: 11647 - RNA, 19 nt, synthetic construct
  source 1..19: mol_type = other RNA
ataagcttcctcctgatga

SEQ ID NO: 11648 - RNA, 19 nt, synthetic construct
  source 1..19: mol_type = other RNA
catcatccagagacgaaaa

SEQ ID NO: 11649 - RNA, 19 nt, synthetic construct
  source 1..19: mol_type = other RNA
atcatccagagacgaaaaa

SEQ ID NO: 11650 - RNA, 19 nt, synthetic construct
  source 1..19: mol_type = other RNA
tcatccagagacgaaaaag

SEQ ID NO: 11651 - RNA, 19 nt, synthetic construct
  source 1..19: mol_type = other RNA
ccagtatcataacaacaca

SEQ ID NO: 11652 - RNA, 19 nt, synthetic construct
  source 1..19: mol_type = other RNA
ctcaatggagtgtactacc

SEQ ID NO: 11653 - RNA, 19 nt, synthetic construct
  source 1..19: mol_type = other RNA
atgatttgtctgtgaaaga

SEQ ID NO: 11654 - RNA, 19 nt, synthetic construct
  source 1..19: mol_type = other RNA
acaaatccctttgctaaaa

SEQ ID NO: 11655 - RNA, 19 nt, synthetic construct
  source 1..19: mol_type = other RNA
aattatcttgagtctacac

SEQ ID NO: 11656 - RNA, 19 nt, synthetic construct
  source 1..19: mol_type = other RNA
acacaaaaattgttcggct

SEQ ID NO: 11657 - RNA, 19 nt, synthetic construct
  source 1..19: mol_type = other RNA
cacaaaaattgttcggctg

SEQ ID NO: 11658 - RNA, 19 nt, synthetic construct
  source 1..19: mol_type = other RNA
tgccttaaaatattcatag

SEQ ID NO: 11659 - RNA, 19 nt, synthetic construct
  source 1..19: mol_type = other RNA
tgaaaactgaaggtagatg

SEQ ID NO: 11660 - RNA, 19 nt, synthetic construct
  source 1..19: mol_type = other RNA
gaaggtagatggtgttata

SEQ ID NO: 11661 - RNA, 19 nt, synthetic construct
  source 1..19: mol_type = other RNA
gtagatggtgttatagtta

SEQ ID NO: 11662 - RNA, 19 nt, synthetic construct
  source 1..19: mol_type = other RNA
tagatggtgttatagttaa

SEQ ID NO: 11663 - RNA, 19 nt, synthetic construct
  source 1..19: mol_type = other RNA
agatggtgttatagttaat

SEQ ID NO: 11664 - RNA, 19 nt, synthetic construct
  source 1..19: mol_type = other RNA
atatgtaccaaggatgtta

SEQ ID NO: 11665 - RNA, 19 nt, synthetic construct
  source 1..19: mol_type = other RNA
ataagcttcctcctgatga

SEQ ID NO: 11666 - RNA, 19 nt, synthetic construct
  source 1..19: mol_type = other RNA
atgatttgtctgtgaaaga

SEQ ID NO: 11667 - RNA, 19 nt, synthetic construct
  source 1..19: mol_type = other RNA
aattatcttgagtctacaa

SEQ ID NO: 11668 - RNA, 19 nt, synthetic construct
  source 1..19: mol_type = other RNA
acacaaaaattgttcggca

SEQ ID NO: 11669 - RNA, 19 nt, synthetic construct
  source 1..19: mol_type = other RNA
cacaaaaattgttcggcta

SEQ ID NO: 11670 - RNA, 19 nt, synthetic construct
  source 1..19: mol_type = other RNA
tgaaaactgaaggtagata

SEQ ID NO: 11671 - RNA, 19 nt, synthetic construct
  source 1..19: mol_type = other RNA
gtagatggtgttatagtta

SEQ ID NO: 11672 - RNA, 19 nt, synthetic construct
  source 1..19: mol_type = other RNA
agatggtgttatagttaaa

SEQ ID NO: 11673 - RNA, 19 nt, synthetic construct
  source 1..19: mol_type = other RNA
atatgtaccaaggatgtta

SEQ ID NO: 11674 - RNA, 19 nt, synthetic construct
  source 1..19: mol_type = other RNA
aattatcttgagtctacaa

SEQ ID NO: 11675 - RNA, 19 nt, synthetic construct
  source 1..19: mol_type = other RNA
aattatcttgagtctacaa

SEQ ID NO: 11676 - RNA, 19 nt, synthetic construct
  source 1..19: mol_type = other RNA
acacaaaaattgttcggca

SEQ ID NO: 11677 - RNA, 19 nt, synthetic construct
  source 1..19: mol_type = other RNA
acgatgaaaatgcagagcc

SEQ ID NO: 11678 - RNA, 19 nt, synthetic construct
  source 1..19: mol_type = other RNA
gacaaaggccacgatgaaa

SEQ ID NO: 11679 - RNA, 19 nt, synthetic construct
  source 1..19: mol_type = other RNA
cttatacactccagagatg

SEQ ID NO: 11680 - RNA, 19 nt, synthetic construct
  source 1..19: mol_type = other RNA
gcttatacactccagagat

SEQ ID NO: 11681 - RNA, 19 nt, synthetic construct
  source 1..19: mol_type = other RNA
tcatcaggaggaagcttat

SEQ ID NO: 11682 - RNA, 19 nt, synthetic construct
  source 1..19: mol_type = other RNA
ttttcgtctctggatgatg

SEQ ID NO: 11683 - RNA, 19 nt, synthetic construct
  source 1..19: mol_type = other RNA
tttttcgtctctggatgat

SEQ ID NO: 11684 - RNA, 19 nt, synthetic construct
  source 1..19: mol_type = other RNA
ctttttcgtctctggatga

SEQ ID NO: 11685 - RNA, 19 nt, synthetic construct
  source 1..19: mol_type = other RNA
tgtgttgttatgatactgg

SEQ ID NO: 11686 - RNA, 19 nt, synthetic construct
  source 1..19: mol_type = other RNA
ggtagtacactccattgag

SEQ ID NO: 11687 - RNA, 19 nt, synthetic construct
  source 1..19: mol_type = other RNA
tctttcacagacaaatcat

SEQ ID NO: 11688 - RNA, 19 nt, synthetic construct
  source 1..19: mol_type = other RNA
ttttagcaaagggatttgt

SEQ ID NO: 11689 - RNA, 19 nt, synthetic construct
  source 1..19: mol_type = other RNA
gtgtagactcaagataatt

SEQ ID NO: 11690 - RNA, 19 nt, synthetic construct
  source 1..19: mol_type = other RNA
agccgaacaatttttgtgt

SEQ ID NO: 11691 - RNA, 19 nt, synthetic construct
  source 1..19: mol_type = other RNA
cagccgaacaatttttgtg

SEQ ID NO: 11692 - RNA, 19 nt, synthetic construct
  source 1..19: mol_type = other RNA
ctatgaatattttaaggca

SEQ ID NO: 11693 - RNA, 19 nt, synthetic construct
  source 1..19: mol_type = other RNA
catctaccttcagttttca

SEQ ID NO: 11694 - RNA, 19 nt, synthetic construct
  source 1..19: mol_type = other RNA
tataacaccatctaccttc

SEQ ID NO: 11695 - RNA, 19 nt, synthetic construct
  source 1..19: mol_type = other RNA
taactataacaccatctac

SEQ ID NO: 11696 - RNA, 19 nt, synthetic construct
  source 1..19: mol_type = other RNA
ttaactataacaccatcta

SEQ ID NO: 11697 - RNA, 19 nt, synthetic construct
  source 1..19: mol_type = other RNA
attaactataacaccatct

SEQ ID NO: 11698 - RNA, 19 nt, synthetic construct
  source 1..19: mol_type = other RNA
taacatccttggtacatat

SEQ ID NO: 11699 - RNA, 19 nt, synthetic construct
  source 1..19: mol_type = other RNA
tcatcaggaggaagcttat

SEQ ID NO: 11700 - RNA, 19 nt, synthetic construct
  source 1..19: mol_type = other RNA
tctttcacagacaaatcat

SEQ ID NO: 11701 - RNA, 19 nt, synthetic construct
  source 1..19: mol_type = other RNA
ttgtagactcaagataatt

SEQ ID NO: 11702 - RNA, 19 nt, synthetic construct
  source 1..19: mol_type = other RNA
tgccgaacaatttttgtgt

SEQ ID NO: 11703 - RNA, 19 nt, synthetic construct
  source 1..19: mol_type = other RNA
tagccgaacaatttttgtg

SEQ ID NO: 11704 - RNA, 19 nt, synthetic construct
  source 1..19: mol_type = other RNA
tatctaccttcagttttca

SEQ ID NO: 11705 - RNA, 19 nt, synthetic construct
  source 1..19: mol_type = other RNA
taactataacaccatctac

SEQ ID NO: 11706 - RNA, 19 nt, synthetic construct
  source 1..19: mol_type = other RNA
tttaactataacaccatct

SEQ ID NO: 11707 - RNA, 19 nt, synthetic construct
  source 1..19: mol_type = other RNA
taacatccttggtacatat

SEQ ID NO: 11708 - RNA, 19 nt, synthetic construct
  source 1..19: mol_type = other RNA
ttgtagactcaagataatt

SEQ ID NO: 11709 - RNA, 19 nt, synthetic construct
  source 1..19: mol_type = other RNA
ttgtagactcaagataatt

SEQ ID NO: 11710 - RNA, 19 nt, synthetic construct
  source 1..19: mol_type = other RNA
tgccgaacaatttttgtgt

SEQ ID NO: 11711-11739 - skipped (29 entries)

SEQ ID NO: 11740 - RNA, 21 nt, synthetic construct
  source 1..21: mol_type = other RNA
  modified_base 1: mod_base = OTHER; note = 2-fluoro-modified nucleoside; note = stearyl
  modified_base 3: mod_base = OTHER; note = 2-fluoro-modified nucleoside
  modified_base 5: mod_base = OTHER; note = 2-fluoro-modified nucleoside
  modified_base 7: mod_base = OTHER; note = 2-fluoro-modified nucleoside
  modified_base 9: mod_base = OTHER; note = 2-fluoro-modified nucleoside
  modified_base 8: mod_base = OTHER; note = 2-fluoro-modified nucleoside
  modified_base 11: mod_base = OTHER; note = 2-fluoro-modified nucleoside
  modified_base 13: mod_base = OTHER; note = 2-fluoro-modified nucleoside
  modified_base 15: mod_base = OTHER; note = 2-fluoro-modified nucleoside
  modified_base 17: mod_base = OTHER; note = 2-fluoro-modified nucleoside
  modified_base 19: mod_base = OTHER; note = 2-fluoro-modified nucleoside
  modified_base 2: mod_base = OTHER; note = 2-O-methyl modified nucleoside
  modified_base 4: mod_base = OTHER; note = 2-O-methyl modified nucleoside
  modified_base 6: mod_base = OTHER; note = 2-O-methyl modified nucleoside
  modified_base 10: mod_base = OTHER; note = 2-O-methyl modified nucleoside
  modified_base 12: mod_base = OTHER; note = 2-O-methyl modified nucleoside
  modified_base 14: mod_base = OTHER; note = 2-O-methyl modified nucleoside
  modified_base 16: mod_base = OTHER; note = 2-O-methyl modified nucleoside
  modified_base 18: mod_base = OTHER; note = 2-O-methyl modified nucleoside
  modified_base 20: mod_base = OTHER; note = 2-O-methyl modified nucleoside
  modified_base 21: mod_base = OTHER; note = 2-O-methyl modified nucleoside
  modified_base 1^2: mod_base = OTHER; note = phosphorothioate linkage
  modified_base 2^3: mod_base = OTHER; note = phosphorothioate linkage
  modified_base 20^21: mod_base = OTHER; note = phosphorothioate linkage
  modified_base 19^20: mod_base = OTHER; note = phosphorothioate linkage
caaccagattgacatcatgtt

SEQ ID NO: 11741 - RNA, 21 nt, synthetic construct
  source 1..21: mol_type = other RNA
  modified_base 1: mod_base = OTHER; note = stearyl; note = 2-fluoro-modified nucleoside
  modified_base 3: mod_base = OTHER; note = 2-fluoro-modified nucleoside
  modified_base 5: mod_base = OTHER; note = 2-fluoro-modified nucleoside
  modified_base 7: mod_base = OTHER; note = 2-fluoro-modified nucleoside
  modified_base 8: mod_base = OTHER; note = 2-fluoro-modified nucleoside
  modified_base 9: mod_base = OTHER; note = 2-fluoro-modified nucleoside
  modified_base 11: mod_base = OTHER; note = 2-fluoro-modified nucleoside
  modified_base 13: mod_base = OTHER; note = 2-fluoro-modified nucleoside
  modified_base 15: mod_base = OTHER; note = 2-fluoro-modified nucleoside
  modified_base 17: mod_base = OTHER; note = 2-fluoro-modified nucleoside
  modified_base 19: mod_base = OTHER; note = 2-fluoro-modified nucleoside
  modified_base 2: mod_base = OTHER; note = 2-O-methyl modified nucleoside
  modified_base 4: mod_base = OTHER; note = 2-O-methyl modified nucleoside
  modified_base 6: mod_base = OTHER; note = 2-O-methyl modified nucleoside
  modified_base 10: mod_base = OTHER; note = 2-O-methyl modified nucleoside
  modified_base 12: mod_base = OTHER; note = 2-O-methyl modified nucleoside
  modified_base 14: mod_base = OTHER; note = 2-O-methyl modified nucleoside
  modified_base 16: mod_base = OTHER; note = 2-O-methyl modified nucleoside
  modified_base 18: mod_base = OTHER; note = 2-O-methyl modified nucleoside
  modified_base 20: mod_base = OTHER; note = 2-O-methyl modified nucleoside
  modified_base 21: mod_base = OTHER; note = 2-O-methyl modified nucleoside
  modified_base 21: mod_base = OTHER; note = 2-O-methyl modified nucleoside
  modified_base 1^2: mod_base = OTHER; note = phosphorothioate linkage
  modified_base 19^20: mod_base = OTHER; note = phosphorothioate linkage
  modified_base 20^21: mod_base = OTHER; note = phosphorothioate linkage
caaccagattgacatcatgtt

SEQ ID NO: 11742 - RNA, 21 nt, synthetic construct
  source 1..21: mol_type = other RNA
  modified_base 1: mod_base = OTHER; note = 2-fluoro-modified nucleoside; note = stearyl
  modified_base 3: mod_base = OTHER; note = 2-fluoro-modified nucleoside
  modified_base 5: mod_base = OTHER; note = 2-fluoro-modified nucleoside
  modified_base 7: mod_base = OTHER; note = 2-fluoro-modified nucleoside
  modified_base 8: mod_base = OTHER; note = 2-fluoro-modified nucleoside
  modified_base 9: mod_base = OTHER; note = 2-fluoro-modified nucleoside
  modified_base 11: mod_base = OTHER; note = 2-fluoro-modified nucleoside
  modified_base 13: mod_base = OTHER; note = 2-fluoro-modified nucleoside
  modified_base 15: mod_base = OTHER; note = 2-fluoro-modified nucleoside
  modified_base 17: mod_base = OTHER; note = 2-fluoro-modified nucleoside
  modified_base 19: mod_base = OTHER; note = 2-fluoro-modified nucleoside
  modified_base 2: mod_base = OTHER; note = 2-O-methyl modified nucleoside
  modified_base 4: mod_base = OTHER; note = 2-O-methyl modified nucleoside
  modified_base 6: mod_base = OTHER; note = 2-O-methyl modified nucleoside
  modified_base 10: mod_base = OTHER; note = 2-O-methyl modified nucleoside
  modified_base 12: mod_base = OTHER; note = 2-O-methyl modified nucleoside
  modified_base 14: mod_base = OTHER; note = 2-O-methyl modified nucleoside
  modified_base 16: mod_base = OTHER; note = 2-O-methyl modified nucleoside
  modified_base 18: mod_base = OTHER; note = 2-O-methyl modified nucleoside
  modified_base 20: mod_base = OTHER; note = 2-O-methyl modified nucleoside
  modified_base 21: mod_base = OTHER; note = 2-O-methyl modified nucleoside
  modified_base 19^20: mod_base = OTHER; note = phosphorothioate linkage
  modified_base 20^21: mod_base = OTHER; note = phosphorothioate linkage
caaccagattgacatcatgtt

SEQ ID NO: 11743 - RNA, 21 nt, synthetic construct
  source 1..21: mol_type = other RNA
  modified_base 1: mod_base = OTHER; note = stearyl; note = 2-fluoro-modified nucleoside
  modified_base 3: mod_base = OTHER; note = 2-fluoro-modified nucleoside
  modified_base 5: mod_base = OTHER; note = 2-fluoro-modified nucleoside
  modified_base 7: mod_base = OTHER; note = 2-fluoro-modified nucleoside
  modified_base 8: mod_base = OTHER; note = 2-fluoro-modified nucleoside
  modified_base 9: mod_base = OTHER; note = 2-fluoro-modified nucleoside
  modified_base 11: mod_base = OTHER; note = 2-fluoro-modified nucleoside
  modified_base 13: mod_base = OTHER; note = 2-fluoro-modified nucleoside
  modified_base 15: mod_base = OTHER; note = 2-fluoro-modified nucleoside
  modified_base 17: mod_base = OTHER; note = 2-fluoro-modified nucleoside
  modified_base 19: mod_base = OTHER; note = 2-fluoro-modified nucleoside
  modified_base 2: mod_base = OTHER; note = 2-O-methyl modified nucleoside
  modified_base 4: mod_base = OTHER; note = 2-O-methyl modified nucleoside
  modified_base 6: mod_base = OTHER; note = 2-O-methyl modified nucleoside
  modified_base 10: mod_base = OTHER; note = 2-O-methyl modified nucleoside
  modified_base 12: mod_base = OTHER; note = 2-O-methyl modified nucleoside
  modified_base 14: mod_base = OTHER; note = 2-O-methyl modified nucleoside
  modified_base 16: mod_base = OTHER; note = 2-O-methyl modified nucleoside
  modified_base 18: mod_base = OTHER; note = 2-O-methyl modified nucleoside
  modified_base 20: mod_base = OTHER; note = 2-O-methyl modified nucleoside
  modified_base 21: mod_base = OTHER; note = 2-O-methyl modified nucleoside
  modified_base 19^20: mod_base = OTHER; note = phosphorothioate linkage
  modified_base 20^21: mod_base = OTHER; note = phosphorothioate linkage
caaccagattgacatcatatt

SEQ ID NO: 11744 - RNA, 21 nt, synthetic construct
  source 1..21: mol_type = other RNA
  modified_base 1: mod_base = OTHER; note = octadecylbenzamide; note = 2-fluoro-modified nucleoside
  modified_base 3: mod_base = OTHER; note = 2-fluoro-modified nucleoside
  modified_base 5: mod_base = OTHER; note = 2-fluoro-modified nucleoside
  modified_base 7: mod_base = OTHER; note = 2-fluoro-modified nucleoside
  modified_base 9: mod_base = OTHER; note = 2-fluoro-modified nucleoside
  modified_base 8: mod_base = OTHER; note = 2-fluoro-modified nucleoside
  modified_base 11: mod_base = OTHER; note = 2-fluoro-modified nucleoside
  modified_base 13: mod_base = OTHER; note = 2-fluoro-modified nucleoside
  modified_base 15: mod_base = OTHER; note = 2-fluoro-modified nucleoside
  modified_base 17: mod_base = OTHER; note = 2-fluoro-modified nucleoside
  modified_base 19: mod_base = OTHER; note = 2-fluoro-modified nucleoside
  modified_base 2: mod_base = OTHER; note = 2-O-methyl modified nucleoside
  modified_base 4: mod_base = OTHER; note = 2-O-methyl modified nucleoside
  modified_base 6: mod_base = OTHER; note = 2-O-methyl modified nucleoside
  modified_base 10: mod_base = OTHER; note = 2-O-methyl modified nucleoside
  modified_base 12: mod_base = OTHER; note = 2-O-methyl modified nucleoside
  modified_base 14: mod_base = OTHER; note = 2-O-methyl modified nucleoside
  modified_base 16: mod_base = OTHER; note = 2-O-methyl modified nucleoside
  modified_base 18: mod_base = OTHER; note = 2-O-methyl modified nucleoside
  modified_base 20: mod_base = OTHER; note = 2-O-methyl modified nucleoside
  modified_base 21: mod_base = OTHER; note = 2-O-methyl modified nucleoside
  modified_base 19^20: mod_base = OTHER; note = phosphorothioate linkage
  modified_base 20^21: mod_base = OTHER; note = phosphorothioate linkage
caaccagattgacatcatgtt

SEQ ID NO: 11745 - RNA, 21 nt, synthetic construct
  source 1..21: mol_type = other RNA
  modified_base 1: mod_base = OTHER; note = 2-fluoro-modified nucleoside; note = octadecylbenzamide
  modified_base 3: mod_base = OTHER; note = 2-fluoro-modified nucleoside
  modified_base 5: mod_base = OTHER; note = 2-fluoro-modified nucleoside
  modified_base 7: mod_base = OTHER; note = 2-fluoro-modified nucleoside
  modified_base 8: mod_base = OTHER; note = 2-fluoro-modified nucleoside
  modified_base 9: mod_base = OTHER; note = 2-fluoro-modified nucleoside
  modified_base 11: mod_base = OTHER; note = 2-fluoro-modified nucleoside
  modified_base 13: mod_base = OTHER; note = 2-fluoro-modified nucleoside
  modified_base 15: mod_base = OTHER; note = 2-fluoro-modified nucleoside
  modified_base 17: mod_base = OTHER; note = 2-fluoro-modified nucleoside
  modified_base 19: mod_base = OTHER; note = 2-fluoro-modified nucleoside
  modified_base 2: mod_base = OTHER; note = 2-O-methyl modified nucleoside
  modified_base 4: mod_base = OTHER; note = 2-O-methyl modified nucleoside
  modified_base 6: mod_base = OTHER; note = 2-O-methyl modified nucleoside
  modified_base 12: mod_base = OTHER; note = 2-O-methyl modified nucleoside
  modified_base 10: mod_base = OTHER; note = 2-O-methyl modified nucleoside
  modified_base 14: mod_base = OTHER; note = 2-O-methyl modified nucleoside
  modified_base 16: mod_base = OTHER; note = 2-O-methyl modified nucleoside
  modified_base 18: mod_base = OTHER; note = 2-O-methyl modified nucleoside
  modified_base 20: mod_base = OTHER; note = 2-O-methyl modified nucleoside
  modified_base 21: mod_base = OTHER; note = 2-O-methyl modified nucleoside
  modified_base 19^20: mod_base = OTHER; note = phosphorothioate linkage
  modified_base 20^21: mod_base = OTHER; note = phosphorothioate linkage
caaccagattgacatcatatt

SEQ ID NO: 11746 - RNA, 21 nt, synthetic construct
  source 1..21: mol_type = other RNA
  modified_base 1: mod_base = OTHER; note = hexadecylbenzamide; note = 2-fluoro-modified nucleoside
  modified_base 3: mod_base = OTHER; note = 2-fluoro-modified nucleoside
  modified_base 5: mod_base = OTHER; note = 2-fluoro-modified nucleoside
  modified_base 7: mod_base = OTHER; note = 2-fluoro-modified nucleoside
  modified_base 8: mod_base = OTHER; note = 2-fluoro-modified nucleoside
  modified_base 9: mod_base = OTHER; note = 2-fluoro-modified nucleoside
  modified_base 11: mod_base = OTHER; note = 2-fluoro-modified nucleoside
  modified_base 13: mod_base = OTHER; note = 2-fluoro-modified nucleoside
  modified_base 15: mod_base = OTHER; note = 2-fluoro-modified nucleoside
  modified_base 17: mod_base = OTHER; note = 2-fluoro-modified nucleoside
  modified_base 19: mod_base = OTHER; note = 2-fluoro-modified nucleoside
  modified_base 2: mod_base = OTHER; note = 2-O-methyl modified nucleoside
  modified_base 4: mod_base = OTHER; note = 2-O-methyl modified nucleoside
  modified_base 6: mod_base = OTHER; note = 2-O-methyl modified nucleoside
  modified_base 10: mod_base = OTHER; note = 2-O-methyl modified nucleoside
  modified_base 12: mod_base = OTHER; note = 2-O-methyl modified nucleoside
  modified_base 14: mod_base = OTHER; note = 2-O-methyl modified nucleoside
  modified_base 16: mod_base = OTHER; note = 2-O-methyl modified nucleoside
  modified_base 18: mod_base = OTHER; note = 2-O-methyl modified nucleoside
  modified_base 20: mod_base = OTHER; note = 2-O-methyl modified nucleoside
  modified_base 21: mod_base = OTHER; note = 2-O-methyl modified nucleoside
  modified_base 19^20: mod_base = OTHER; note = phosphorothioate linkage
  modified_base 20^21: mod_base = OTHER; note = phosphorothioate linkage
caaccagattgacatcatatt

SEQ ID NO: 11747 - RNA, 21 nt, synthetic construct
  source 1..21: mol_type = other RNA
  modified_base 1: mod_base = OTHER; note = octadecylcyclohexyl; note = 2-fluoro-modified nucleoside
  modified_base 3: mod_base = OTHER; note = 2-fluoro-modified nucleoside
  modified_base 5: mod_base = OTHER; note = 2-fluoro-modified nucleoside
  modified_base 7: mod_base = OTHER; note = 2-fluoro-modified nucleoside
  modified_base 8: mod_base = OTHER; note = 2-fluoro-modified nucleoside
  modified_base 9: mod_base = OTHER; note = 2-fluoro-modified nucleoside
  modified_base 11: mod_base = OTHER; note = 2-fluoro-modified nucleoside
  modified_base 13: mod_base = OTHER; note = 2-fluoro-modified nucleoside
  modified_base 15: mod_base = OTHER; note = 2-fluoro-modified nucleoside
  modified_base 17: mod_base = OTHER; note = 2-fluoro-modified nucleoside
  modified_base 19: mod_base = OTHER; note = 2-fluoro-modified nucleoside
  modified_base 2: mod_base = OTHER; note = 2-O-methyl modified nucleoside
  modified_base 4: mod_base = OTHER; note = 2-O-methyl modified nucleoside
  modified_base 6: mod_base = OTHER; note = 2-O-methyl modified nucleoside
  modified_base 10: mod_base = OTHER; note = 2-O-methyl modified nucleoside
  modified_base 12: mod_base = OTHER; note = 2-O-methyl modified nucleoside
  modified_base 14: mod_base = OTHER; note = 2-O-methyl modified nucleoside
  modified_base 16: mod_base = OTHER; note = 2-O-methyl modified nucleoside
  modified_base 18: mod_base = OTHER; note = 2-O-methyl modified nucleoside
  modified_base 20: mod_base = OTHER; note = 2-O-methyl modified nucleoside
  modified_base 21: mod_base = OTHER; note = 2-O-methyl modified nucleoside
  modified_base 19^20: mod_base = OTHER; note = phosphorothioate linkage
  modified_base 20^21: mod_base = OTHER; note = phosphorothioate linkage
caaccagattgacatcatatt

SEQ ID NO: 11748 - RNA, 21 nt, synthetic construct
  source 1..21: mol_type = other RNA
  modified_base 1: mod_base = OTHER; note = t-butylphenyl; note = 2-fluoro-modified nucleoside
  modified_base 3: mod_base = OTHER; note = 2-fluoro-modified nucleoside
  modified_base 5: mod_base = OTHER; note = 2-fluoro-modified nucleoside
  modified_base 7: mod_base = OTHER; note = 2-fluoro-modified nucleoside
  modified_base 8: mod_base = OTHER; note = 2-fluoro-modified nucleoside
  modified_base 9: mod_base = OTHER; note = 2-fluoro-modified nucleoside
  modified_base 11: mod_base = OTHER; note = 2-fluoro-modified nucleoside
  modified_base 13: mod_base = OTHER; note = 2-fluoro-modified nucleoside
  modified_base 15: mod_base = OTHER; note = 2-fluoro-modified nucleoside
  modified_base 17: mod_base = OTHER; note = 2-fluoro-modified nucleoside
  modified_base 19: mod_base = OTHER; note = 2-fluoro-modified nucleoside
  modified_base 2: mod_base = OTHER; note = 2-O-methyl modified nucleoside
  modified_base 4: mod_base = OTHER; note = 2-O-methyl modified nucleoside
  modified_base 6: mod_base = OTHER; note = 2-O-methyl modified nucleoside
  modified_base 10: mod_base = OTHER; note = 2-O-methyl modified nucleoside
  modified_base 12: mod_base = OTHER; note = 2-O-methyl modified nucleoside
  modified_base 14: mod_base = OTHER; note = 2-O-methyl modified nucleoside
  modified_base 16: mod_base = OTHER; note = 2-O-methyl modified nucleoside
  modified_base 18: mod_base = OTHER; note = 2-O-methyl modified nucleoside
  modified_base 20: mod_base = OTHER; note = 2-O-methyl modified nucleoside
  modified_base 21: mod_base = OTHER; note = 2-O-methyl modified nucleoside
  modified_base 19^20: mod_base = OTHER; note = phosphorothioate linkage
  modified_base 20^21: mod_base = OTHER; note = phosphorothioate linkage
  modified_base 1^2: mod_base = OTHER; note = phosphorothioate linkage
  modified_base 2^3: mod_base = OTHER; note = phosphorothioate linkage
caaccagattgacatcatgtt

SEQ ID NO: 11749 - RNA, 21 nt, synthetic construct
  source 1..21: mol_type = other RNA
  modified_base 1: mod_base = OTHER; note = n-butylphenyl; note = 2-fluoro-modified nucleoside
  modified_base 3: mod_base = OTHER; note = 2-fluoro-modified nucleoside
  modified_base 5: mod_base = OTHER; note = 2-fluoro-modified nucleoside
  modified_base 7: mod_base = OTHER; note = 2-fluoro-modified nucleoside
  modified_base 8: mod_base = OTHER; note = 2-fluoro-modified nucleoside
  modified_base 9: mod_base = OTHER; note = 2-fluoro-modified nucleoside
  modified_base 11: mod_base = OTHER; note = 2-fluoro-modified nucleoside
  modified_base 13: mod_base = OTHER; note = 2-fluoro-modified nucleoside
  modified_base 15: mod_base = OTHER; note = 2-fluoro-modified nucleoside
  modified_base 17: mod_base = OTHER; note = 2-fluoro-modified nucleoside
  modified_base 19: mod_base = OTHER; note = 2-fluoro-modified nucleoside
  modified_base 2: mod_base = OTHER; note = 2-O-methyl modified nucleoside
  modified_base 4: mod_base = OTHER; note = 2-O-methyl modified nucleoside
  modified_base 6: mod_base = OTHER; note = 2-O-methyl modified nucleoside
  modified_base 10: mod_base = OTHER; note = 2-O-methyl modified nucleoside
  modified_base 12: mod_base = OTHER; note = 2-O-methyl modified nucleoside
  modified_base 16: mod_base = OTHER; note = 2-O-methyl modified nucleoside
  modified_base 18: mod_base = OTHER; note = 2-O-methyl modified nucleoside
  modified_base 20: mod_base = OTHER; note = 2-O-methyl modified nucleoside
  modified_base 21: mod_base = OTHER; note = 2-O-methyl modified nucleoside
  modified_base 19^20: mod_base = OTHER; note = phosphorothioate linkage
  modified_base 20^21: mod_base = OTHER; note = phosphorothioate linkage
  modified_base 1^2: mod_base = OTHER; note = phosphorothioate linkage
  modified_base 2^3: mod_base = OTHER; note = phosphorothioate linkage
caaccagattgacatcatgtt

SEQ ID NO: 11750 - RNA, 21 nt, synthetic construct
  source 1..21: mol_type = other RNA
  modified_base 1^2: mod_base = OTHER; note = phosphorothioate linkage
  modified_base 2^3: mod_base = OTHER; note = phosphorothioate linkage
  modified_base 19^20: mod_base = OTHER; note = phosphorothioate linkage
  modified_base 20^21: mod_base = OTHER; note = phosphorothioate linkage
  modified_base 1: mod_base = OTHER; note = 2-fluoro-modified nucleoside; note = octylphenyl
  modified_base 3: mod_base = OTHER; note = 2-fluoro-modified nucleoside
  modified_base 5: mod_base = OTHER; note = 2-fluoro-modified nucleoside
  modified_base 7: mod_base = OTHER; note = 2-fluoro-modified nucleoside
  modified_base 8: mod_base = OTHER; note = 2-fluoro-modified nucleoside
  modified_base 9: mod_base = OTHER; note = 2-fluoro-modified nucleoside
  modified_base 11: mod_base = OTHER; note = 2-fluoro-modified nucleoside
  modified_base 13: mod_base = OTHER; note = 2-fluoro-modified nucleoside
  modified_base 15: mod_base = OTHER; note = 2-fluoro-modified nucleoside
  modified_base 17: mod_base = OTHER; note = 2-fluoro-modified nucleoside
  modified_base 19: mod_base = OTHER; note = 2-fluoro-modified nucleoside
  modified_base 2: mod_base = OTHER; note = 2-O-methyl modified nucleoside
  modified_base 4: mod_base = OTHER; note = 2-O-methyl modified nucleoside
  modified_base 6: mod_base = OTHER; note = 2-O-methyl modified nucleoside
  modified_base 10: mod_base = OTHER; note = 2-O-methyl modified nucleoside
  modified_base 12: mod_base = OTHER; note = 2-O-methyl modified nucleoside
  modified_base 14: mod_base = OTHER; note = 2-O-methyl modified nucleoside
  modified_base 16: mod_base = OTHER; note = 2-O-methyl modified nucleoside
  modified_base 18: mod_base = OTHER; note = 2-O-methyl modified nucleoside
  modified_base 20: mod_base = OTHER; note = 2-O-methyl modified nucleoside
  modified_base 21: mod_base = OTHER; note = 2-O-methyl modified nucleoside
  modified_base 1^2: mod_base = OTHER; note = phosphorothioate linkage
  modified_base 2^3: mod_base = OTHER; note = phosphorothioate linkage
  modified_base 19^20: mod_base = OTHER; note = phosphorothioate linkage
  modified_base 20^21: mod_base = OTHER; note = phosphorothioate linkage
caaccagattgacatcatgtt

SEQ ID NO: 11751 - RNA, 21 nt, synthetic construct
  source 1..21: mol_type = other RNA
  modified_base 1: mod_base = OTHER; note = dodecylphenyl; note = 2-fluoro-modified nucleoside
  modified_base 3: mod_base = OTHER; note = 2-fluoro-modified nucleoside
  modified_base 5: mod_base = OTHER; note = 2-fluoro-modified nucleoside
  modified_base 7: mod_base = OTHER; note = 2-fluoro-modified nucleoside
  modified_base 8: mod_base = OTHER; note = 2-fluoro-modified nucleoside
  modified_base 9: mod_base = OTHER; note = 2-fluoro-modified nucleoside
  modified_base 11: mod_base = OTHER; note = 2-fluoro-modified nucleoside
  modified_base 13: mod_base = OTHER; note = 2-fluoro-modified nucleoside
  modified_base 15: mod_base = OTHER; note = 2-fluoro-modified nucleoside
  modified_base 17: mod_base = OTHER; note = 2-fluoro-modified nucleoside
  modified_base 19: mod_base = OTHER; note = 2-fluoro-modified nucleoside
  modified_base 2: mod_base = OTHER; note = 2-O-methyl modified nucleoside
  modified_base 4: mod_base = OTHER; note = 2-O-methyl modified nucleoside
  modified_base 6: mod_base = OTHER; note = 2-O-methyl modified nucleoside
  modified_base 10: mod_base = OTHER; note = 2-O-methyl modified nucleoside
  modified_base 12: mod_base = OTHER; note = 2-O-methyl modified nucleoside
  modified_base 14: mod_base = OTHER; note = 2-O-methyl modified nucleoside
  modified_base 16: mod_base = OTHER; note = 2-O-methyl modified nucleoside
  modified_base 18: mod_base = OTHER; note = 2-O-methyl modified nucleoside
  modified_base 20: mod_base = OTHER; note = 2-O-methyl modified nucleoside
  modified_base 21: mod_base = OTHER; note = 2-O-methyl modified nucleoside
  modified_base 1^2: mod_base = OTHER; note = phosphorothioate linkage
  modified_base 2^3: mod_base = OTHER; note = phosphorothioate linkage
  modified_base 19^20: mod_base = OTHER; note = phosphorothioate linkage
  modified_base 20^21: mod_base = OTHER; note = phosphorothioate linkage
caaccagattgacatcatgtt

SEQ ID NO: 11752 - RNA, 21 nt, synthetic construct
  source 1..21: mol_type = other RNA
  modified_base 2: mod_base = OTHER; note = 2-fluoro-modified nucleoside
  modified_base 4: mod_base = OTHER; note = 2-fluoro-modified nucleoside
  modified_base 6: mod_base = OTHER; note = 2-fluoro-modified nucleoside
  modified_base 8: mod_base = OTHER; note = 2-fluoro-modified nucleoside
  modified_base 10: mod_base = OTHER; note = 2-fluoro-modified nucleoside
  modified_base 14: mod_base = OTHER; note = 2-fluoro-modified nucleoside
  modified_base 16: mod_base = OTHER; note = 2-fluoro-modified nucleoside
  modified_base 18: mod_base = OTHER; note = 2-fluoro-modified nucleoside
  modified_base 1: mod_base = OTHER; note = 2-O-methyl modified nucleoside
  modified_base 3: mod_base = OTHER; note = 2-O-methyl modified nucleoside
  modified_base 5: mod_base = OTHER; note = 2-O-methyl modified nucleoside
  modified_base 7: mod_base = OTHER; note = 2-O-methyl modified nucleoside
  modified_base 9: mod_base = OTHER; note = 2-O-methyl modified nucleoside
  modified_base 11: mod_base = OTHER; note = 2-O-methyl modified nucleoside
  modified_base 12: mod_base = OTHER; note = 2-O-methyl modified nucleoside
  modified_base 13: mod_base = OTHER; note = 2-O-methyl modified nucleoside
  modified_base 15: mod_base = OTHER; note = 2-O-methyl modified nucleoside
  modified_base 17: mod_base = OTHER; note = 2-O-methyl modified nucleoside
  modified_base 19: mod_base = OTHER; note = 2-O-methyl modified nucleoside
  modified_base 20: mod_base = OTHER; note = 2-O-methyl modified nucleoside
  modified_base 21: mod_base = OTHER; note = 2-O-methyl modified nucleoside
  modified_base 1^2: mod_base = OTHER; note = phosphorothioate linkage
  modified_base 2^3: mod_base = OTHER; note = phosphorothioate linkage
  modified_base 19^20: mod_base = OTHER; note = phosphorothioate linkage
  modified_base 20^21: mod_base = OTHER; note = phosphorothioate linkage
catgatgtcaatctggttgtt

SEQ ID NO: 11753 - RNA, 21 nt, synthetic construct
  source 1..21: mol_type = other RNA
  modified_base 2: mod_base = OTHER; note = 2-fluoro-modified nucleoside
  modified_base 4: mod_base = OTHER; note = 2-fluoro-modified nucleoside
  modified_base 6: mod_base = OTHER; note = 2-fluoro-modified nucleoside
  modified_base 8: mod_base = OTHER; note = 2-fluoro-modified nucleoside
  modified_base 10: mod_base = OTHER; note = 2-fluoro-modified nucleoside
  modified_base 14: mod_base = OTHER; note = 2-fluoro-modified nucleoside
  modified_base 16: mod_base = OTHER; note = 2-fluoro-modified nucleoside
  modified_base 18: mod_base = OTHER; note = 2-fluoro-modified nucleoside
  modified_base 1: mod_base = OTHER; note = 5' vinyl phosphonate; note = 2-O-methyl modified nucleoside
  modified_base 3: mod_base = OTHER; note = 2-O-methyl modified nucleoside
  modified_base 5: mod_base = OTHER; note = 2-O-methyl modified nucleoside
  modified_base 7: mod_base = OTHER; note = 2-O-methyl modified nucleoside
  modified_base 9: mod_base = OTHER; note = 2-O-methyl modified nucleoside
  modified_base 11: mod_base = OTHER; note = 2-O-methyl modified nucleoside
  modified_base 12: mod_base = OTHER; note = 2-O-methyl modified nucleoside
  modified_base 13: mod_base = OTHER; note = 2-O-methyl modified nucleoside
  modified_base 15: mod_base = OTHER; note = 2-O-methyl modified nucleoside
  modified_base 17: mod_base = OTHER; note = 2-O-methyl modified nucleoside
  modified_base 19: mod_base = OTHER; note = 2-O-methyl modified nucleoside
  modified_base 20: mod_base = OTHER; note = 2-O-methyl modified nucleoside
  modified_base 21: mod_base = OTHER; note = 2-O-methyl modified nucleoside
  modified_base 1^2: mod_base = OTHER; note = phosphorothioate linkage
  modified_base 2^3: mod_base = OTHER; note = phosphorothioate linkage
  modified_base 19^20: mod_base = OTHER; note = phosphorothioate linkage
  modified_base 20^21: mod_base = OTHER; note = phosphorothioate linkage
tatgatgtcaatctggttgtt

SEQ ID NO: 11754 - RNA, 21 nt, synthetic construct
  source 1..21: mol_type = other RNA
  modified_base 2: mod_base = OTHER; note = 2-fluoro-modified nucleoside
  modified_base 4: mod_base = OTHER; note = 2-fluoro-modified nucleoside
  modified_base 6: mod_base = OTHER; note = 2-fluoro-modified nucleoside
  modified_base 8: mod_base = OTHER; note = 2-fluoro-modified nucleoside
  modified_base 10: mod_base = OTHER; note = 2-fluoro-modified nucleoside
  modified_base 14: mod_base = OTHER; note = 2-fluoro-modified nucleoside
  modified_base 16: mod_base = OTHER; note = 2-fluoro-modified nucleoside
  modified_base 18: mod_base = OTHER; note = 2-fluoro-modified nucleoside
  modified_base 1: mod_base = OTHER; note = 2-O-methyl modified nucleoside
  modified_base 3: mod_base = OTHER; note = 2-O-methyl modified nucleoside
  modified_base 5: mod_base = OTHER; note = 2-O-methyl modified nucleoside
  modified_base 7: mod_base = OTHER; note = 2-O-methyl modified nucleoside
  modified_base 9: mod_base = OTHER; note = 2-O-methyl modified nucleoside
  modified_base 11: mod_base = OTHER; note = 2-O-methyl modified nucleoside
  modified_base 12: mod_base = OTHER; note = 2-O-methyl modified nucleoside
  modified_base 13: mod_base = OTHER; note = 2-O-methyl modified nucleoside
  modified_base 15: mod_base = OTHER; note = 2-O-methyl modified nucleoside
  modified_base 17: mod_base = OTHER; note = 2-O-methyl modified nucleoside
  modified_base 19: mod_base = OTHER; note = 2-O-methyl modified nucleoside
  modified_base 20: mod_base = OTHER; note = 2-O-methyl modified nucleoside
  modified_base 21: mod_base = OTHER; note = 2-O-methyl modified nucleoside
  modified_base 1^2: mod_base = OTHER; note = phosphorothioate linkage
  modified_base 2^3: mod_base = OTHER; note = phosphorothioate linkage
  modified_base 19^20: mod_base = OTHER; note = phosphorothioate linkage
  modified_base 20^21: mod_base = OTHER; note = phosphorothioate linkage
tatgatgtcaatctggttgtt

SEQ ID NO: 11755 - RNA, 19 nt, synthetic construct
  source 1..19: mol_type = other RNA
ggctctgcattttcatcga

SEQ ID NO: 11756 - RNA, 19 nt, synthetic construct
  source 1..19: mol_type = other RNA
catctctggagtgtataaa

SEQ ID NO: 11757 - RNA, 19 nt, synthetic construct
  source 1..19: mol_type = other RNA
atctctggagtgtataaga

SEQ ID NO: 11758 - RNA, 19 nt, synthetic construct
  source 1..19: mol_type = other RNA
catcatccagagacgaaaa

SEQ ID NO: 11759 - RNA, 19 nt, synthetic construct
  source 1..19: mol_type = other RNA
atcatccagagacgaaaaa

SEQ ID NO: 11760 - RNA, 19 nt, synthetic construct
  source 1..19: mol_type = other RNA
tcatccagagacgaaaaaa

SEQ ID NO: 11761 - RNA, 19 nt, synthetic construct
  source 1..19: mol_type = other RNA
ctcaatggagtgtactaca

SEQ ID NO: 11762 - RNA, 19 nt, synthetic construct
  source 1..19: mol_type = other RNA
atatgtaccaaggatgtta

SEQ ID NO: 11763 - RNA, 19 nt, synthetic construct
  source 1..19: mol_type = other RNA
aattatcttgagtctacaa

SEQ ID NO: 11764 - RNA, 19 nt, synthetic construct
  source 1..19: mol_type = other RNA
acacaaaaattgttcggca

SEQ ID NO: 11765 - RNA, 19 nt, synthetic construct
  source 1..19: mol_type = other RNA
cacaaaaattgttcggcta

SEQ ID NO: 11766 - RNA, 19 nt, synthetic construct
  source 1..19: mol_type = other RNA
gaaggtagatggtgttata

SEQ ID NO: 11767 - RNA, 19 nt, synthetic construct
  source 1..19: mol_type = other RNA
gtagatggtgttatagtta

SEQ ID NO: 11768 - RNA, 19 nt, synthetic construct
  source 1..19: mol_type = other RNA
tcgatgaaaatgcagagcc

SEQ ID NO: 11769 - RNA, 19 nt, synthetic construct
  source 1..19: mol_type = other RNA
tttatacactccagagatg

SEQ ID NO: 11770 - RNA, 19 nt, synthetic construct
  source 1..19: mol_type = other RNA
tcttatacactccagagat

SEQ ID NO: 11771 - RNA, 19 nt, synthetic construct
  source 1..19: mol_type = other RNA
ttttcgtctctggatgatg

SEQ ID NO: 11772 - RNA, 19 nt, synthetic construct
  source 1..19: mol_type = other RNA
tttttcgtctctggatgat

SEQ ID NO: 11773 - RNA, 19 nt, synthetic construct
  source 1..19: mol_type = other RNA
ttttttcgtctctggatga

SEQ ID NO: 11774 - RNA, 19 nt, synthetic construct
  source 1..19: mol_type = other RNA
tgtagtacactccattgag

SEQ ID NO: 11775 - RNA, 19 nt, synthetic construct
  source 1..19: mol_type = other RNA
taacatccttggtacatat

SEQ ID NO: 11776 - RNA, 19 nt, synthetic construct
  source 1..19: mol_type = other RNA
ttgtagactcaagataatt

SEQ ID NO: 11777 - RNA, 19 nt, synthetic construct
  source 1..19: mol_type = other RNA
tgccgaacaatttttgtgt

SEQ ID NO: 11778 - RNA, 19 nt, synthetic construct
  source 1..19: mol_type = other RNA
tagccgaacaatttttgtg

SEQ ID NO: 11779 - RNA, 19 nt, synthetic construct
  source 1..19: mol_type = other RNA
tataacaccatctaccttc

SEQ ID NO: 11780 - RNA, 19 nt, synthetic construct
  source 1..19: mol_type = other RNA
taactataacaccatctac

SEQ ID NO: 11781-11785 - skipped (5 entries)

SEQ ID NO: 11786 - RNA, 21 nt, synthetic construct
  source 1..21: mol_type = other RNA
  modified_base 1: mod_base = OTHER; note = 2-fluoro-modified nucleoside
  modified_base 5: mod_base = OTHER; note = 2-fluoro-modified nucleoside
  modified_base 3: mod_base = OTHER; note = 2-fluoro-modified nucleoside
  modified_base 7: mod_base = OTHER; note = 2-fluoro-modified nucleoside
  modified_base 8: mod_base = OTHER; note = 2-fluoro-modified nucleoside
  modified_base 9: mod_base = OTHER; note = 2-fluoro-modified nucleoside
  modified_base 11: mod_base = OTHER; note = 2-fluoro-modified nucleoside
  modified_base 13: mod_base = OTHER; note = 2-fluoro-modified nucleoside
  modified_base 15: mod_base = OTHER; note = 2-fluoro-modified nucleoside
  modified_base 17: mod_base = OTHER; note = 2-fluoro-modified nucleoside
  modified_base 19: mod_base = OTHER; note = 2-fluoro-modified nucleoside
  modified_base 2: mod_base = OTHER; note = 2-O-methyl modified nucleoside
  modified_base 4: mod_base = OTHER; note = 2-O-methyl modified nucleoside
  modified_base 6: mod_base = OTHER; note = 2-O-methyl modified nucleoside
  modified_base 10: mod_base = OTHER; note = 2-O-methyl modified nucleoside
  modified_base 12: mod_base = OTHER; note = 2-O-methyl modified nucleoside
  modified_base 14: mod_base = OTHER; note = 2-O-methyl modified nucleoside
  modified_base 16: mod_base = OTHER; note = 2-O-methyl modified nucleoside
  modified_base 18: mod_base = OTHER; note = 2-O-methyl modified nucleoside
  modified_base 20: mod_base = OTHER; note = 2-O-methyl modified nucleoside
  modified_base 21: mod_base = OTHER; note = 2-O-methyl modified nucleoside
  modified_base 19^20: mod_base = OTHER; note = phosphorothioate linkage
  modified_base 20^21: mod_base = OTHER; note = phosphorothioate linkage
caaccagattgacatcatgtt

SEQ ID NO: 11787 - RNA, 21 nt, synthetic construct
  source 1..21: mol_type = other RNA
  modified_base 2: mod_base = OTHER; note = 2-fluoro-modified nucleoside
  modified_base 4: mod_base = OTHER; note = 2-fluoro-modified nucleoside
  modified_base 6: mod_base = OTHER; note = 2-fluoro-modified nucleoside
  modified_base 8: mod_base = OTHER; note = 2-fluoro-modified nucleoside
  modified_base 10: mod_base = OTHER; note = 2-fluoro-modified nucleoside
  modified_base 14: mod_base = OTHER; note = 2-fluoro-modified nucleoside
  modified_base 16: mod_base = OTHER; note = 2-fluoro-modified nucleoside
  modified_base 18: mod_base = OTHER; note = 2-fluoro-modified nucleoside
  modified_base 1: mod_base = OTHER; note = 2-O-methyl modified nucleoside
  modified_base 3: mod_base = OTHER; note = 2-O-methyl modified nucleoside
  modified_base 5: mod_base = OTHER; note = 2-O-methyl modified nucleoside
  modified_base 11: mod_base = OTHER; note = 2-O-methyl modified nucleoside
  modified_base 7: mod_base = OTHER; note = 2-O-methyl modified nucleoside
  modified_base 8: mod_base = OTHER; note = 2-O-methyl modified nucleoside
  modified_base 9: mod_base = OTHER; note = 2-O-methyl modified nucleoside
  modified_base 15: mod_base = OTHER; note = 2-O-methyl modified nucleoside
  modified_base 17: mod_base = OTHER; note = 2-O-methyl modified nucleoside
  modified_base 19: mod_base = OTHER; note = 2-O-methyl modified nucleoside
  modified_base 20: mod_base = OTHER; note = 2-O-methyl modified nucleoside
  modified_base 21: mod_base = OTHER; note = 2-O-methyl modified nucleoside
  modified_base 19^20: mod_base = OTHER; note = phosphorothioate linkage
  modified_base 20^21: mod_base = OTHER; note = phosphorothioate linkage
  modified_base 1^2: mod_base = OTHER; note = phosphorothioate linkage
  modified_base 2^3: mod_base = OTHER; note = phosphorothioate linkage
catgatgtcaatctggttgtt

SEQ ID NO: 11788 - skipped

SEQ ID NO: 11789 - RNA, 21 nt, synthetic construct
  source 1..21: mol_type = other RNA
  modified_base 1: mod_base = OTHER; note = 2-fluoro-modified nucleoside; note = stearyl
  modified_base 3: mod_base = OTHER; note = 2-fluoro-modified nucleoside
  modified_base 5: mod_base = OTHER; note = 2-fluoro-modified nucleoside
  modified_base 7: mod_base = OTHER; note = 2-fluoro-modified nucleoside
  modified_base 9: mod_base = OTHER; note = 2-fluoro-modified nucleoside
  modified_base 8: mod_base = OTHER; note = 2-fluoro-modified nucleoside
  modified_base 11: mod_base = OTHER; note = 2-fluoro-modified nucleoside
  modified_base 13: mod_base = OTHER; note = 2-fluoro-modified nucleoside
  modified_base 15: mod_base = OTHER; note = 2-fluoro-modified nucleoside
  modified_base 17: mod_base = OTHER; note = 2-fluoro-modified nucleoside
  modified_base 19: mod_base = OTHER; note = 2-fluoro-modified nucleoside
  modified_base 2: mod_base = OTHER; note = 2-O-methyl modified nucleoside
  modified_base 4: mod_base = OTHER; note = 2-O-methyl modified nucleoside
  modified_base 6: mod_base = OTHER; note = 2-O-methyl modified nucleoside
  modified_base 10: mod_base = OTHER; note = 2-O-methyl modified nucleoside
  modified_base 12: mod_base = OTHER; note = 2-O-methyl modified nucleoside
  modified_base 14: mod_base = OTHER; note = 2-O-methyl modified nucleoside
  modified_base 16: mod_base = OTHER; note = 2-O-methyl modified nucleoside
  modified_base 18: mod_base = OTHER; note = 2-O-methyl modified nucleoside
  modified_base 20: mod_base = OTHER; note = 2-O-methyl modified nucleoside
  modified_base 21: mod_base = OTHER; note = 2-O-methyl modified nucleoside
  modified_base 19^20: mod_base = OTHER; note = phosphorothioate linkage
  modified_base 20^21: mod_base = OTHER; note = phosphorothioate linkage
caaccagattgacatcatgtt

SEQ ID NO: 11790 - RNA, 21 nt, synthetic construct
  source 1..21: mol_type = other RNA
  modified_base 1: mod_base = OTHER; note = 2-fluoro-modified nucleoside
  modified_base 3: mod_base = OTHER; note = 2-fluoro-modified nucleoside
  modified_base 5: mod_base = OTHER; note = 2-fluoro-modified nucleoside
  modified_base 7: mod_base = OTHER; note = 2-fluoro-modified nucleoside
  modified_base 8: mod_base = OTHER; note = 2-fluoro-modified nucleoside
  modified_base 9: mod_base = OTHER; note = 2-fluoro-modified nucleoside
  modified_base 11: mod_base = OTHER; note = 2-fluoro-modified nucleoside
  modified_base 13: mod_base = OTHER; note = 2-fluoro-modified nucleoside
  modified_base 15: mod_base = OTHER; note = 2-fluoro-modified nucleoside
  modified_base 17: mod_base = OTHER; note = 2-fluoro-modified nucleoside
  modified_base 19: mod_base = OTHER; note = 2-fluoro-modified nucleoside
  modified_base 2: mod_base = OTHER; note = 2-O-methyl modified nucleoside
  modified_base 4: mod_base = OTHER; note = 2-O-methyl modified nucleoside
  modified_base 6: mod_base = OTHER; note = 2-O-methyl modified nucleoside
  modified_base 10: mod_base = OTHER; note = 2-O-methyl modified nucleoside
  modified_base 12: mod_base = OTHER; note = 2-O-methyl modified nucleoside
  modified_base 14: mod_base = OTHER; note = 2-O-methyl modified nucleoside
  modified_base 16: mod_base = OTHER; note = 2-O-methyl modified nucleoside
  modified_base 18: mod_base = OTHER; note = 2-O-methyl modified nucleoside
  modified_base 20: mod_base = OTHER; note = 2-O-methyl modified nucleoside
  modified_base 21: mod_base = OTHER; note = 2-O-methyl modified nucleoside
  modified_base 19^20: mod_base = OTHER; note = phosphorothioate linkage
  modified_base 20^21: mod_base = OTHER; note = phosphorothioate linkage
caaccagattgacatcatgtt

SEQ ID NO: 11791 - RNA, 21 nt, synthetic construct
  source 1..21: mol_type = other RNA
  modified_base 1: mod_base = OTHER; note = octadecylbenzamide; note = 2-fluoro-modified nucleoside
  modified_base 3: mod_base = OTHER; note = 2-fluoro-modified nucleoside
  modified_base 5: mod_base = OTHER; note = 2-fluoro-modified nucleoside
  modified_base 7: mod_base = OTHER; note = 2-fluoro-modified nucleoside
  modified_base 8: mod_base = OTHER; note = 2-fluoro-modified nucleoside
  modified_base 9: mod_base = OTHER; note = 2-fluoro-modified nucleoside
  modified_base 12: mod_base = OTHER; note = 2-fluoro-modified nucleoside
  modified_base 14: mod_base = OTHER; note = 2-fluoro-modified nucleoside
  modified_base 16: mod_base = OTHER; note = 2-fluoro-modified nucleoside
  modified_base 18: mod_base = OTHER; note = 2-fluoro-modified nucleoside
  modified_base 2: mod_base = OTHER; note = 2-O-methyl modified nucleoside
  modified_base 4: mod_base = OTHER; note = 2-O-methyl modified nucleoside
  modified_base 6: mod_base = OTHER; note = 2-O-methyl modified nucleoside
  modified_base 10: mod_base = OTHER; note = 2-O-methyl modified nucleoside
  modified_base 12: mod_base = OTHER; note = 2-O-methyl modified nucleoside
  modified_base 14: mod_base = OTHER; note = 2-O-methyl modified nucleoside
  modified_base 16: mod_base = OTHER; note = 2-O-methyl modified nucleoside
  modified_base 18: mod_base = OTHER; note = 2-O-methyl modified nucleoside
  modified_base 20: mod_base = OTHER; note = 2-O-methyl modified nucleoside
  modified_base 21: mod_base = OTHER; note = 2-O-methyl modified nucleoside
  modified_base 19^20: mod_base = OTHER; note = phosphorothioate linkage
  modified_base 20^21: mod_base = OTHER; note = phosphorothioate linkage
caaccagattgacatcatatt

SEQ ID NO: 11792 - RNA, 21 nt, synthetic construct
  source 1..21: mol_type = other RNA
  modified_base 2: mod_base = OTHER; note = 2-fluoro-modified nucleoside
  modified_base 4: mod_base = OTHER; note = 2-fluoro-modified nucleoside
  modified_base 6: mod_base = OTHER; note = 2-fluoro-modified nucleoside
  modified_base 8: mod_base = OTHER; note = 2-fluoro-modified nucleoside
  modified_base 10: mod_base = OTHER; note = 2-fluoro-modified nucleoside
  modified_base 14: mod_base = OTHER; note = 2-fluoro-modified nucleoside
  modified_base 18: mod_base = OTHER; note = 2-fluoro-modified nucleoside
  modified_base 18: mod_base = OTHER; note = 2-fluoro-modified nucleoside
  modified_base 1: mod_base = OTHER; note = 2-O-methyl modified nucleoside
  modified_base 3: mod_base = OTHER; note = 2-O-methyl modified nucleoside
  modified_base 5: mod_base = OTHER; note = 2-O-methyl modified nucleoside
  modified_base 7: mod_base = OTHER; note = 2-O-methyl modified nucleoside
  modified_base 9: mod_base = OTHER; note = 2-O-methyl modified nucleoside
  modified_base 11: mod_base = OTHER; note = 2-O-methyl modified nucleoside
  modified_base 12: mod_base = OTHER; note = 2-O-methyl modified nucleoside
  modified_base 13: mod_base = OTHER; note = 2-O-methyl modified nucleoside
  modified_base 15: mod_base = OTHER; note = 2-O-methyl modified nucleoside
  modified_base 17: mod_base = OTHER; note = 2-O-methyl modified nucleoside
  modified_base 19: mod_base = OTHER; note = 2-O-methyl modified nucleoside
  modified_base 20: mod_base = OTHER; note = 2-O-methyl modified nucleoside
  modified_base 21: mod_base = OTHER; note = 2-O-methyl modified nucleoside
  modified_base 1^2: mod_base = OTHER; note = phosphorothioate linkage
  modified_base 2^3: mod_base = OTHER; note = phosphorothioate linkage
  modified_base 19^20: mod_base = OTHER; note = phosphorothioate linkage
  modified_base 20^21: mod_base = OTHER; note = phosphorothioate linkage
catgatgtcaatctggttgtt

SEQ ID NO: 11793 - RNA, 21 nt, synthetic construct
  source 1..21: mol_type = other RNA
  modified_base 2: mod_base = OTHER; note = 2-fluoro-modified nucleoside
  modified_base 4: mod_base = OTHER; note = 2-fluoro-modified nucleoside
  modified_base 6: mod_base = OTHER; note = 2-fluoro-modified nucleoside
  modified_base 8: mod_base = OTHER; note = 2-fluoro-modified nucleoside
  modified_base 10: mod_base = OTHER; note = 2-fluoro-modified nucleoside
  modified_base 14: mod_base = OTHER; note = 2-fluoro-modified nucleoside
  modified_base 16: mod_base = OTHER; note = 2-fluoro-modified nucleoside
  modified_base 18: mod_base = OTHER; note = 2-fluoro-modified nucleoside
  modified_base 1: mod_base = OTHER; note = 2-O-methyl modified nucleoside
  modified_base 3: mod_base = OTHER; note = 2-O-methyl modified nucleoside
  modified_base 5: mod_base = OTHER; note = 2-O-methyl modified nucleoside
  modified_base 7: mod_base = OTHER; note = 2-O-methyl modified nucleoside
  modified_base 9: mod_base = OTHER; note = 2-O-methyl modified nucleoside
  modified_base 11: mod_base = OTHER; note = 2-O-methyl modified nucleoside
  modified_base 12: mod_base = OTHER; note = 2-O-methyl modified nucleoside
  modified_base 13: mod_base = OTHER; note = 2-O-methyl modified nucleoside
  modified_base 15: mod_base = OTHER; note = 2-O-methyl modified nucleoside
  modified_base 17: mod_base = OTHER; note = 2-O-methyl modified nucleoside
  modified_base 19: mod_base = OTHER; note = 2-O-methyl modified nucleoside
  modified_base 20: mod_base = OTHER; note = 2-O-methyl modified nucleoside
  modified_base 21: mod_base = OTHER; note = 2-O-methyl modified nucleoside
  modified_base 1^2: mod_base = OTHER; note = phosphorothioate linkage
  modified_base 2^3: mod_base = OTHER; note = phosphorothioate linkage
  modified_base 19^20: mod_base = OTHER; note = phosphorothioate linkage
  modified_base 20^21: mod_base = OTHER; note = phosphorothioate linkage
catgatgtcaatctggttgtt

SEQ ID NO: 11794 - RNA, 21 nt, synthetic construct
  source 1..21: mol_type = other RNA
  modified_base 1^2: mod_base = OTHER; note = phosphorothioate linkage
  modified_base 2^3: mod_base = OTHER; note = phosphorothioate linkage
  modified_base 19^20: mod_base = OTHER; note = phosphorothioate linkage
  modified_base 20^21: mod_base = OTHER; note = phosphorothioate linkage
  modified_base 2: mod_base = OTHER; note = 2-fluoro-modified nucleoside
  modified_base 4: mod_base = OTHER; note = 2-fluoro-modified nucleoside
  modified_base 6: mod_base = OTHER; note = 2-fluoro-modified nucleoside
  modified_base 8: mod_base = OTHER; note = 2-fluoro-modified nucleoside
  modified_base 10: mod_base = OTHER; note = 2-fluoro-modified nucleoside
  modified_base 14: mod_base = OTHER; note = 2-fluoro-modified nucleoside
  modified_base 16: mod_base = OTHER; note = 2-fluoro-modified nucleoside
  modified_base 18: mod_base = OTHER; note = 2-fluoro-modified nucleoside
  modified_base 1: mod_base = OTHER; note = 2-O-methyl modified nucleoside
  modified_base 3: mod_base = OTHER; note = 2-O-methyl modified nucleoside
  modified_base 5: mod_base = OTHER; note = 2-O-methyl modified nucleoside
  modified_base 7: mod_base = OTHER; note = 2-O-methyl modified nucleoside
  modified_base 9: mod_base = OTHER; note = 2-O-methyl modified nucleoside
  modified_base 11: mod_base = OTHER; note = 2-O-methyl modified nucleoside
  modified_base 12: mod_base = OTHER; note = 2-O-methyl modified nucleoside
  modified_base 13: mod_base = OTHER; note = 2-O-methyl modified nucleoside
  modified_base 15: mod_base = OTHER; note = 2-O-methyl modified nucleoside
  modified_base 17: mod_base = OTHER; note = 2-O-methyl modified nucleoside
  modified_base 19: mod_base = OTHER; note = 2-O-methyl modified nucleoside
  modified_base 20: mod_base = OTHER; note = 2-O-methyl modified nucleoside
  modified_base 21: mod_base = OTHER; note = 2-O-methyl modified nucleoside
catgatgtcaatctggttgtt

SEQ ID NO: 11795 - RNA, 21 nt, synthetic construct
  source 1..21: mol_type = other RNA
  modified_base 2: mod_base = OTHER; note = 2-fluoro-modified nucleoside
  modified_base 4: mod_base = OTHER; note = 2-fluoro-modified nucleoside
  modified_base 6: mod_base = OTHER; note = 2-fluoro-modified nucleoside
  modified_base 8: mod_base = OTHER; note = 2-fluoro-modified nucleoside
  modified_base 10: mod_base = OTHER; note = 2-fluoro-modified nucleoside
  modified_base 14: mod_base = OTHER; note = 2-fluoro-modified nucleoside
  modified_base 16: mod_base = OTHER; note = 2-fluoro-modified nucleoside
  modified_base 18: mod_base = OTHER; note = 2-fluoro-modified nucleoside
  modified_base 1: mod_base = OTHER; note = 2-O-methyl modified nucleoside
  modified_base 3: mod_base = OTHER; note = 2-O-methyl modified nucleoside
  modified_base 5: mod_base = OTHER; note = 2-O-methyl modified nucleoside
  modified_base 7: mod_base = OTHER; note = 2-O-methyl modified nucleoside
  modified_base 9: mod_base = OTHER; note = 2-O-methyl modified nucleoside
  modified_base 11: mod_base = OTHER; note = 2-O-methyl modified nucleoside
  modified_base 12: mod_base = OTHER; note = 2-O-methyl modified nucleoside
  modified_base 13: mod_base = OTHER; note = 2-O-methyl modified nucleoside
  modified_base 15: mod_base = OTHER; note = 2-O-methyl modified nucleoside
  modified_base 17: mod_base = OTHER; note = 2-O-methyl modified nucleoside
  modified_base 19: mod_base = OTHER; note = 2-O-methyl modified nucleoside
  modified_base 20: mod_base = OTHER; note = 2-O-methyl modified nucleoside
  modified_base 21: mod_base = OTHER; note = 2-O-methyl modified nucleoside
  modified_base 1^2: mod_base = OTHER; note = phosphorothioate linkage
  modified_base 2^3: mod_base = OTHER; note = phosphorothioate linkage
  modified_base 19^20: mod_base = OTHER; note = phosphorothioate linkage
  modified_base 20^21: mod_base = OTHER; note = phosphorothioate linkage
catgatgtcaatctggttgtt

SEQ ID NO: 11796 - RNA, 21 nt, synthetic construct
  source 1..21: mol_type = other RNA
  modified_base 2: mod_base = OTHER; note = 2-fluoro-modified nucleoside
  modified_base 4: mod_base = OTHER; note = 2-fluoro-modified nucleoside
  modified_base 6: mod_base = OTHER; note = 2-fluoro-modified nucleoside
  modified_base 8: mod_base = OTHER; note = 2-fluoro-modified nucleoside
  modified_base 10: mod_base = OTHER; note = 2-fluoro-modified nucleoside
  modified_base 14: mod_base = OTHER; note = 2-fluoro-modified nucleoside
  modified_base 16: mod_base = OTHER; note = 2-fluoro-modified nucleoside
  modified_base 18: mod_base = OTHER; note = 2-fluoro-modified nucleoside
  modified_base 1: mod_base = OTHER; note = 2-O-methyl modified nucleoside
  modified_base 3: mod_base = OTHER; note = 2-O-methyl modified nucleoside
  modified_base 5: mod_base = OTHER; note = 2-O-methyl modified nucleoside
  modified_base 7: mod_base = OTHER; note = 2-O-methyl modified nucleoside
  modified_base 9: mod_base = OTHER; note = 2-O-methyl modified nucleoside
  modified_base 11: mod_base = OTHER; note = 2-O-methyl modified nucleoside
  modified_base 12: mod_base = OTHER; note = 2-O-methyl modified nucleoside
  modified_base 13: mod_base = OTHER; note = 2-O-methyl modified nucleoside
  modified_base 15: mod_base = OTHER; note = 2-O-methyl modified nucleoside
  modified_base 17: mod_base = OTHER; note = 2-O-methyl modified nucleoside
  modified_base 19: mod_base = OTHER; note = 2-O-methyl modified nucleoside
  modified_base 20: mod_base = OTHER; note = 2-O-methyl modified nucleoside
  modified_base 21: mod_base = OTHER; note = 2-O-methyl modified nucleoside
  modified_base 1^2: mod_base = OTHER; note = phosphorothioate linkage
  modified_base 2^3: mod_base = OTHER; note = phosphorothioate linkage
  modified_base 19^20: mod_base = OTHER; note = phosphorothioate linkage
  modified_base 20^21: mod_base = OTHER; note = phosphorothioate linkage
catgatgtcaatctggttgtt

SEQ ID NO: 11797 - RNA, 21 nt, synthetic construct
  source 1..21: mol_type = other RNA
  modified_base 2: mod_base = OTHER; note = 2-fluoro-modified nucleoside
  modified_base 4: mod_base = OTHER; note = 2-fluoro-modified nucleoside
  modified_base 6: mod_base = OTHER; note = 2-fluoro-modified nucleoside
  modified_base 8: mod_base = OTHER; note = 2-fluoro-modified nucleoside
  modified_base 10: mod_base = OTHER; note = 2-fluoro-modified nucleoside
  modified_base 14: mod_base = OTHER; note = 2-fluoro-modified nucleoside
  modified_base 16: mod_base = OTHER; note = 2-fluoro-modified nucleoside
  modified_base 18: mod_base = OTHER; note = 2-fluoro-modified nucleoside
  modified_base 1: mod_base = OTHER; note = 2-O-methyl modified nucleoside
  modified_base 3: mod_base = OTHER; note = 2-O-methyl modified nucleoside
  modified_base 5: mod_base = OTHER; note = 2-O-methyl modified nucleoside
  modified_base 7: mod_base = OTHER; note = 2-O-methyl modified nucleoside
  modified_base 9: mod_base = OTHER; note = 2-O-methyl modified nucleoside
  modified_base 11: mod_base = OTHER; note = 2-O-methyl modified nucleoside
  modified_base 12: mod_base = OTHER; note = 2-O-methyl modified nucleoside
  modified_base 13: mod_base = OTHER; note = 2-O-methyl modified nucleoside
  modified_base 15: mod_base = OTHER; note = 2-O-methyl modified nucleoside
  modified_base 17: mod_base = OTHER; note = 2-O-methyl modified nucleoside
  modified_base 19: mod_base = OTHER; note = 2-O-methyl modified nucleoside
  modified_base 21: mod_base = OTHER; note = 2-O-methyl modified nucleoside
  modified_base 1^2: mod_base = OTHER; note = phosphorothioate linkage
  modified_base 3^4: mod_base = OTHER; note = phosphorothioate linkage
  modified_base 19^20: mod_base = OTHER; note = phosphorothioate linkage
  modified_base 20^21: mod_base = OTHER; note = phosphorothioate linkage
catgatgtcaatctggttgtt

SEQ ID NO: 11798 - RNA, 21 nt, synthetic construct
  source 1..21: mol_type = other RNA
  modified_base 2: mod_base = OTHER; note = 2-fluoro-modified nucleoside
  modified_base 4: mod_base = OTHER; note = 2-fluoro-modified nucleoside
  modified_base 6: mod_base = OTHER; note = 2-fluoro-modified nucleoside
  modified_base 8: mod_base = OTHER; note = 2-fluoro-modified nucleoside
  modified_base 10: mod_base = OTHER; note = 2-fluoro-modified nucleoside
  modified_base 14: mod_base = OTHER; note = 2-fluoro-modified nucleoside
  modified_base 16: mod_base = OTHER; note = 2-fluoro-modified nucleoside
  modified_base 18: mod_base = OTHER; note = 2-fluoro-modified nucleoside
  modified_base 1: mod_base = OTHER; note = 2-O-methyl modified nucleoside
  modified_base 3: mod_base = OTHER; note = 2-O-methyl modified nucleoside
  modified_base 5: mod_base = OTHER; note = 2-O-methyl modified nucleoside
  modified_base 7: mod_base = OTHER; note = 2-O-methyl modified nucleoside
  modified_base 9: mod_base = OTHER; note = 2-O-methyl modified nucleoside
  modified_base 11: mod_base = OTHER; note = 2-O-methyl modified nucleoside
  modified_base 12: mod_base = OTHER; note = 2-O-methyl modified nucleoside
  modified_base 13: mod_base = OTHER; note = 2-O-methyl modified nucleoside
  modified_base 15: mod_base = OTHER; note = 2-O-methyl modified nucleoside
  modified_base 17: mod_base = OTHER; note = 2-O-methyl modified nucleoside
  modified_base 19: mod_base = OTHER; note = 2-O-methyl modified nucleoside
  modified_base 20: mod_base = OTHER; note = 2-O-methyl modified nucleoside
  modified_base 21: mod_base = OTHER; note = 2-O-methyl modified nucleoside
  modified_base 1^2: mod_base = OTHER; note = phosphorothioate linkage
  modified_base 2^3: mod_base = OTHER; note = phosphorothioate linkage
  modified_base 19^20: mod_base = OTHER; note = phosphorothioate linkage
  modified_base 20^21: mod_base = OTHER; note = phosphorothioate linkage
catgatgtcaatctggttgtt

SEQ ID NO: 11799 - RNA, 21 nt, synthetic construct
  source 1..21: mol_type = other RNA
  modified_base 2: mod_base = OTHER; note = 2-fluoro-modified nucleoside
  modified_base 4: mod_base = OTHER; note = 2-fluoro-modified nucleoside
  modified_base 6: mod_base = OTHER; note = 2-fluoro-modified nucleoside
  modified_base 8: mod_base = OTHER; note = 2-fluoro-modified nucleoside
  modified_base 10: mod_base = OTHER; note = 2-fluoro-modified nucleoside
  modified_base 14: mod_base = OTHER; note = 2-fluoro-modified nucleoside
  modified_base 16: mod_base = OTHER; note = 2-fluoro-modified nucleoside
  modified_base 18: mod_base = OTHER; note = 2-fluoro-modified nucleoside
  modified_base 1: mod_base = OTHER; note = 2-O-methyl modified nucleoside; note = 5' vinyl phosphonate
  modified_base 3: mod_base = OTHER; note = 2-O-methyl modified nucleoside
  modified_base 5: mod_base = OTHER; note = 2-O-methyl modified nucleoside
  modified_base 7: mod_base = OTHER; note = 2-O-methyl modified nucleoside
  modified_base 9: mod_base = OTHER; note = 2-O-methyl modified nucleoside
  modified_base 11: mod_base = OTHER; note = 2-O-methyl modified nucleoside
  modified_base 12: mod_base = OTHER; note = 2-O-methyl modified nucleoside
  modified_base 13: mod_base = OTHER; note = 2-O-methyl modified nucleoside
  modified_base 15: mod_base = OTHER; note = 2-O-methyl modified nucleoside
  modified_base 17: mod_base = OTHER; note = 2-O-methyl modified nucleoside
  modified_base 19: mod_base = OTHER; note = 2-O-methyl modified nucleoside
  modified_base 20: mod_base = OTHER; note = 2-O-methyl modified nucleoside
  modified_base 21: mod_base = OTHER; note = 2-O-methyl modified nucleoside
  modified_base 1^2: mod_base = OTHER; note = phosphorothioate linkage
  modified_base 2^3: mod_base = OTHER; note = phosphorothioate linkage
  modified_base 19^20: mod_base = OTHER; note = phosphorothioate linkage
  modified_base 20^21: mod_base = OTHER; note = phosphorothioate linkage
tatgatgtcaatctggttgtt

SEQ ID NO: 11800 - RNA, 21 nt, synthetic construct
  source 1..21: mol_type = other RNA
  modified_base 2: mod_base = OTHER; note = 2-fluoro-modified nucleoside
  modified_base 4: mod_base = OTHER; note = 2-fluoro-modified nucleoside
  modified_base 6: mod_base = OTHER; note = 2-fluoro-modified nucleoside
  modified_base 8: mod_base = OTHER; note = 2-fluoro-modified nucleoside
  modified_base 10: mod_base = OTHER; note = 2-fluoro-modified nucleoside
  modified_base 14: mod_base = OTHER; note = 2-fluoro-modified nucleoside
  modified_base 16: mod_base = OTHER; note = 2-fluoro-modified nucleoside
  modified_base 18: mod_base = OTHER; note = 2-fluoro-modified nucleoside
  modified_base 1: mod_base = OTHER; note = 5' vinyl phosphonate; note = 2-O-methyl modified nucleoside
  modified_base 3: mod_base = OTHER; note = 2-O-methyl modified nucleoside
  modified_base 5: mod_base = OTHER; note = 2-O-methyl modified nucleoside
  modified_base 7: mod_base = OTHER; note = 2-O-methyl modified nucleoside
  modified_base 9: mod_base = OTHER; note = 2-O-methyl modified nucleoside
  modified_base 11: mod_base = OTHER; note = 2-O-methyl modified nucleoside
  modified_base 12: mod_base = OTHER; note = 2-O-methyl modified nucleoside
  modified_base 13: mod_base = OTHER; note = 2-O-methyl modified nucleoside
  modified_base 15: mod_base = OTHER; note = 2-O-methyl modified nucleoside
  modified_base 17: mod_base = OTHER; note = 2-O-methyl modified nucleoside
  modified_base 19: mod_base = OTHER; note = 2-O-methyl modified nucleoside
  modified_base 20: mod_base = OTHER; note = 2-O-methyl modified nucleoside
  modified_base 21: mod_base = OTHER; note = 2-O-methyl modified nucleoside
  modified_base 1^2: mod_base = OTHER; note = phosphorothioate linkage
  modified_base 2^3: mod_base = OTHER; note = phosphorothioate linkage
  modified_base 19^20: mod_base = OTHER; note = phosphorothioate linkage
  modified_base 20^21: mod_base = OTHER; note = phosphorothioate linkage
tatgatgtcaatctggttgtt

SEQ ID NO: 11801 - RNA, 21 nt, synthetic construct
  source 1..21: mol_type = other RNA
  modified_base 2: mod_base = OTHER; note = 2-fluoro-modified nucleoside
  modified_base 4: mod_base = OTHER; note = 2-fluoro-modified nucleoside
  modified_base 6: mod_base = OTHER; note = 2-fluoro-modified nucleoside
  modified_base 8: mod_base = OTHER; note = 2-fluoro-modified nucleoside
  modified_base 10: mod_base = OTHER; note = 2-fluoro-modified nucleoside
  modified_base 14: mod_base = OTHER; note = 2-fluoro-modified nucleoside
  modified_base 16: mod_base = OTHER; note = 2-fluoro-modified nucleoside
  modified_base 18: mod_base = OTHER; note = 2-fluoro-modified nucleoside
  modified_base 1: mod_base = OTHER; note = 2-O-methyl modified nucleoside; note = 5' vinyl phosphonate
  modified_base 3: mod_base = OTHER; note = 2-O-methyl modified nucleoside
  modified_base 5: mod_base = OTHER; note = 2-O-methyl modified nucleoside
  modified_base 7: mod_base = OTHER; note = 2-O-methyl modified nucleoside
  modified_base 9: mod_base = OTHER; note = 2-O-methyl modified nucleoside
  modified_base 11: mod_base = OTHER; note = 2-O-methyl modified nucleoside
  modified_base 12: mod_base = OTHER; note = 2-O-methyl modified nucleoside
  modified_base 13: mod_base = OTHER; note = 2-O-methyl modified nucleoside
  modified_base 15: mod_base = OTHER; note = 2-O-methyl modified nucleoside
  modified_base 17: mod_base = OTHER; note = 2-O-methyl modified nucleoside
  modified_base 18: mod_base = OTHER; note = 2-fluoro-modified nucleoside
  modified_base 20: mod_base = OTHER; note = 2-O-methyl modified nucleoside
  modified_base 21: mod_base = OTHER; note = 2-O-methyl modified nucleoside
  modified_base 1^2: mod_base = OTHER; note = phosphorothioate linkage
  modified_base 2^3: mod_base = OTHER; note = phosphorothioate linkage
  modified_base 19^20: mod_base = OTHER; note = phosphorothioate linkage
  modified_base 20^21: mod_base = OTHER; note = phosphorothioate linkage
  modified_base 19: mod_base = OTHER; note = 2-O-methyl modified nucleoside
tatgatgtcaatctggttgtt

SEQ ID NO: 11802 - RNA, 21 nt, synthetic construct
  source 1..21: mol_type = other RNA
  modified_base 2: mod_base = OTHER; note = 2-fluoro-modified nucleoside
  modified_base 4: mod_base = OTHER; note = 2-fluoro-modified nucleoside
  modified_base 6: mod_base = OTHER; note = 2-fluoro-modified nucleoside
  modified_base 8: mod_base = OTHER; note = 2-fluoro-modified nucleoside
  modified_base 10: mod_base = OTHER; note = 2-fluoro-modified nucleoside
  modified_base 14: mod_base = OTHER; note = 2-fluoro-modified nucleoside
  modified_base 16: mod_base = OTHER; note = 2-fluoro-modified nucleoside
  modified_base 18: mod_base = OTHER; note = 2-fluoro-modified nucleoside
  modified_base 1: mod_base = OTHER; note = 2-O-methyl modified nucleoside; note = 5' vinyl phosphonate
  modified_base 3: mod_base = OTHER; note = 2-O-methyl modified nucleoside
  modified_base 5: mod_base = OTHER; note = 2-O-methyl modified nucleoside
  modified_base 7: mod_base = OTHER; note = 2-O-methyl modified nucleoside
  modified_base 9: mod_base = OTHER; note = 2-O-methyl modified nucleoside
  modified_base 11: mod_base = OTHER; note = 2-O-methyl modified nucleoside
  modified_base 12: mod_base = OTHER; note = 2-O-methyl modified nucleoside
  modified_base 13: mod_base = OTHER; note = 2-O-methyl modified nucleoside
  modified_base 15: mod_base = OTHER; note = 2-O-methyl modified nucleoside
  modified_base 17: mod_base = OTHER; note = 2-O-methyl modified nucleoside
  modified_base 19: mod_base = OTHER; note = 2-O-methyl modified nucleoside
  modified_base 20: mod_base = OTHER; note = 2-O-methyl modified nucleoside
  modified_base 21: mod_base = OTHER; note = 2-O-methyl modified nucleoside
  modified_base 1^2: mod_base = OTHER; note = phosphorothioate linkage
  modified_base 2^3: mod_base = OTHER; note = phosphorothioate linkage
  modified_base 19^20: mod_base = OTHER; note = phosphorothioate linkage
  modified_base 20^21: mod_base = OTHER; note = phosphorothioate linkage
tatgatgtcaatctggttgtt

SEQ ID NO: 11803 - RNA, 21 nt, synthetic construct
  source 1..21: mol_type = other RNA
  modified_base 6: mod_base = OTHER; note = 2-O-methyl modified nucleoside
  modified_base 9: mod_base = OTHER; note = 2-O-methyl modified nucleoside
  modified_base 13: mod_base = OTHER; note = 2-O-methyl modified nucleoside
  modified_base 1..2: mod_base = OTHER; note = phosphorothioate linkage
  modified_base 2..3: mod_base = OTHER; note = phosphorothioate linkage
  modified_base 19..20: mod_base = OTHER; note = phosphorothioate linkage
  modified_base 20..21: mod_base = OTHER; note = phosphorothioate linkage
  modified_base 14: mod_base = OTHER; note = 2-fluoro-modified nucleoside
  modified_base 7: mod_base = OTHER; note = 2-fluoro-modified nucleoside
  modified_base 15: mod_base = OTHER; note = 2-O-methyl modified nucleoside
  modified_base 12: mod_base = OTHER; note = 2-fluoro-modified nucleoside
  modified_base 5: mod_base = OTHER; note = 2-O-methyl modified nucleoside
  modified_base 4: mod_base = OTHER; note = 2-O-methyl modified nucleoside
  modified_base 11: mod_base = OTHER; note = 2-O-methyl modified nucleoside
  modified_base 17: mod_base = OTHER; note = 2-O-methyl modified nucleoside
  modified_base 20: mod_base = OTHER; note = 2-O-methyl modified nucleoside
  modified_base 16: mod_base = OTHER; note = 2-fluoro-modified nucleoside
  modified_base 18: mod_base = OTHER; note = 2-fluoro-modified nucleoside
  modified_base 1: mod_base = OTHER; note = 2-O-methyl modified nucleoside
  modified_base 19: mod_base = OTHER; note = 2-O-methyl modified nucleoside
  modified_base 8: mod_base = OTHER; note = 2-O-methyl modified nucleoside
  modified_base 10: mod_base = OTHER; note = 2-fluoro-modified nucleoside
  modified_base 3: mod_base = OTHER; note = 2-O-methyl modified nucleoside
  modified_base 21: mod_base = OTHER; note = 2-O-methyl modified nucleoside
  modified_base 2: mod_base = OTHER; note = 2-fluoro-modified nucleoside
tatgatgtcaatctggttgtt

SEQ ID NO: 11804 - DNA, 20 bp, synthetic construct
  source 1..20: mol_type = other DNA
acctccacccctaccatggc

SEQ ID NO: 11805 - RNA, 21 nt, synthetic construct
  source 1..21: mol_type = other RNA
aattatcttgagtctacaatt

SEQ ID NO: 11806 - RNA, 21 nt, synthetic construct
  source 1..21: mol_type = other RNA
atatgtaccaaggatgttatt

SEQ ID NO: 11807 - RNA, 21 nt, synthetic construct
  source 1..21: mol_type = other RNA
aattatcttgagtctacaatt

SEQ ID NO: 11808 - RNA, 21 nt, synthetic construct
  source 1..21: mol_type = other RNA
aattatcttgagtctacaatt

SEQ ID NO: 11809 - RNA, 21 nt, synthetic construct
  source 1..21: mol_type = other RNA
acacaaaaattgttcggcatt

SEQ ID NO: 11810 - RNA, 19 nt, synthetic construct
  source 1..19: mol_type = other RNA
aattatcttgagtctacaa

SEQ ID NO: 11811 - RNA, 19 nt, synthetic construct
  source 1..19: mol_type = other RNA
atatgtaccaaggatgtta

SEQ ID NO: 11812 - RNA, 19 nt, synthetic construct
  source 1..19: mol_type = other RNA
aattatcttgagtctacaa

SEQ ID NO: 11813 - RNA, 19 nt, synthetic construct
  source 1..19: mol_type = other RNA
aattatcttgagtctacaa

SEQ ID NO: 11814 - RNA, 19 nt, synthetic construct
  source 1..19: mol_type = other RNA
acacaaaaattgttcggca

SEQ ID NO: 11815 - RNA, 17 nt, synthetic construct
  source 1..17: mol_type = other RNA
attatcttgagtctaca

SEQ ID NO: 11816 - RNA, 17 nt, synthetic construct
  source 1..17: mol_type = other RNA
tatgtaccaaggatgtt

SEQ ID NO: 11817 - RNA, 17 nt, synthetic construct
  source 1..17: mol_type = other RNA
attatcttgagtctaca

SEQ ID NO: 11818 - RNA, 17 nt, synthetic construct
  source 1..17: mol_type = other RNA
attatcttgagtctaca

SEQ ID NO: 11819 - RNA, 17 nt, synthetic construct
  source 1..17: mol_type = other RNA
cacaaaaattgttcggc

SEQ ID NO: 11820 - RNA, 21 nt, synthetic construct
  source 1..21: mol_type = other RNA
ttgtagactcaagataatttt

SEQ ID NO: 11821 - RNA, 21 nt, synthetic construct
  source 1..21: mol_type = other RNA
taacatccttggtacatattt

SEQ ID NO: 11822 - RNA, 21 nt, synthetic construct
  source 1..21: mol_type = other RNA
ttgtagactcaagataatttt

SEQ ID NO: 11823 - RNA, 21 nt, synthetic construct
  source 1..21: mol_type = other RNA
ttgtagactcaagataatttt

SEQ ID NO: 11824 - RNA, 21 nt, synthetic construct
  source 1..21: mol_type = other RNA
tgccgaacaatttttgtgttt

SEQ ID NO: 11825 - RNA, 19 nt, synthetic construct
  source 1..19: mol_type = other RNA
ttgtagactcaagataatt

SEQ ID NO: 11826 - RNA, 19 nt, synthetic construct
  source 1..19: mol_type = other RNA
taacatccttggtacatat

SEQ ID NO: 11827 - RNA, 19 nt, synthetic construct
  source 1..19: mol_type = other RNA
ttgtagactcaagataatt

SEQ ID NO: 11828 - RNA, 19 nt, synthetic construct
  source 1..19: mol_type = other RNA
ttgtagactcaagataatt

SEQ ID NO: 11829 - RNA, 19 nt, synthetic construct
  source 1..19: mol_type = other RNA
tgccgaacaatttttgtgt

SEQ ID NO: 11830 - RNA, 17 nt, synthetic construct
  source 1..17: mol_type = other RNA
tgtagactcaagataat

SEQ ID NO: 11831 - RNA, 17 nt, synthetic construct
  source 1..17: mol_type = other RNA
aacatccttggtacata

SEQ ID NO: 11832 - RNA, 17 nt, synthetic construct
  source 1..17: mol_type = other RNA
tgtagactcaagataat

SEQ ID NO: 11833 - RNA, 17 nt, synthetic construct
  source 1..17: mol_type = other RNA
tgtagactcaagataat

SEQ ID NO: 11834 - RNA, 17 nt, synthetic construct
  source 1..17: mol_type = other RNA
gccgaacaatttttgtg
